United States Patent Application Publication US 2022/0175781 A1 - sequence listing, part 2

SEQ ID NO: 6646 - protein, 423 aa, Artificial Sequence
  Description of Artificial Sequence: Synthetic Construct
MSGISLIAALAVDRVIGMENAMPWNLPADLAWFKRNTLNKPVIMGRHTWESIGRPLPGRKNIILSSQPGTDDRVTWVKSVDEAIAACGDVPEIMVIGGGRVHEQFLPKAQKLYLTHIDAEVEGDTHFPDYEPDDWESVFSEFHDADAQNSHSYCFEILERRHMIETYNQTSPRSAATGLPISMKIFMYLLTVFLITQMIGSALFAVYLHRRLDKIEDERNLHEDFVFMKTIQRCNTGERSLSLLNCEEIKSQFEGFVKDIMLNKEETKKENSFEMQKGDQNPQIAAHVISEASSKTTSVLQWAEKGYYTMSNNLVTLENGKQLTVKRQGLYYIYAQVTFCSNREASSQAPFIASLCLKSPGRFERILLRAANTHSSAKPCGQQSIHLGGVFELQPGASVFVNVTDPSQVSHGTGFTSFGLLKL

SEQ ID NO: 6647 - DNA, 1272 bp, Artificial Sequence
  Description of Artificial Sequence: Synthetic Construct
atgtcagggatctcacttatcgcagccttggcagttgatcgtgtgatcggcatggaaaatgcgatgccatggaatcttccggccgacctcgcttggttcaaacgcaacaccctgaacaaacccgttattatgggccgacatacatgggaaagtatcggcaggccattgcccggtcggaaaaacataatcctttcctcccagccgggcacggacgatagagtgacttgggtcaaatcagttgacgaggccattgctgcctgcggcgatgtacccgagattatggttatcggaggtggccgagttcatgagcagtttctgcccaaagcgcagaagttgtaccttactcatatagatgcagaggtagagggcgacacgcatttccccgactacgaaccggatgattgggaatccgtattttccgaattccacgacgcggatgcccaaaacagtcactcttactgttttgaaattcttgagcgacgccatatgatcgaaacatacaaccaaacttctccccgatctgcggccactggactgcccatcagcatgaaaatttttatgtatttacttactgtttttcttatcacccagatgattgggtcagcactttttgctgtgtatcttcatagaaggttggacaagatagaagatgaaaggaatcttcatgaagattttgtattcatgaaaacgatacagagatgcaacacaggagaaagatccttatccttactgaactgtgaggagattaaaagccagtttgaaggctttgtgaaggatataatgttaaacaaagaggagacgaagaaagaaaacagctttgaaatgcaaaaaggtgatcagaatcctcaaattgcggcacatgtcataagtgaggccagcagtaaaacaacatctgtgttacagtgggctgaaaaaggatactacaccatgagcaacaacttggtaaccctggaaaatgggaaacagctgaccgttaaaagacaaggactctattatatctatgcccaagtcaccttctgttccaatcgggaagcttcgagtcaagctccatttatagccagcctctgcctaaagtcccccggtagattcgagagaatcttactcagagctgcaaatacccacagttccgccaaaccttgcgggcaacaatccattcacttgggaggagtatttgaattgcaaccaggtgcttcggtgtttgtcaatgtgactgatccaagccaagtgagccatggcactggcttcacgtcctttggcttactcaaactctga

SEQ ID NO: 6648 - protein, 423 aa, Artificial Sequence
  Description of Artificial Sequence: Synthetic Construct
MSGISLIAALAVDRVIGMENAMPWNLPADLAWFKRNTLNKPVIMGRHTWESIGRPLPGRKNIILSSQPGTDDRVTWVKSVDEAIAACGDVPEIMVIGGGRVIEQFLPKAQKLYLTHIDAEVEGDTHFPDYEPDDWESVFSEFHDADAQNSHSYCFEILERRHMIETYNQTSPRSAATGLPISMKIFMYLLTVFLITQMIGSALFAVYLHRRLDKIEDERNLHEDFVFMKTIQRCNTGERSLSLLNCEEIKSQFEGFVKDIMLNKEETKKENSFEMQKGDQNPQIAAHVISEASSKTTSVLQWAEKGYYTMSNNLVTLENGKQLTVKRQGLYYIYAQVTFCSNREASSQAPFIASLCLKSPGRFERILLRAANTHSSAKPCGQQSIHLGGVFELQPGASVFVNVTDPSQVSHGTGFTSFGLLKL

SEQ ID NO: 6649 - DNA, 1272 bp, Artificial Sequence
  Description of Artificial Sequence: Synthetic Construct
atgtcagggatctcacttatcgcagccttggcagttgatcgtgtgatcggcatggaaaatgcgatgccatggaatcttccggccgacctcgcttggttcaaacgcaacaccctgaacaaacccgttattatgggccgacatacatgggaaagtatcggcaggccattgcccggtcggaaaaacataatcctttcctcccagccgggcacggacgatagagtgacttgggtcaaatcagttgacgaggccattgctgcctgcggcgatgtacccgagattatggttatcggaggtggccgagttattgagcagtttctgcccaaagcgcagaagttgtaccttactcatatagatgcagaggtagagggcgacacgcatttccccgactacgaaccggatgattgggaatccgtattttccgaattccacgacgcggatgcccaaaacagtcactcttactgttttgaaattcttgagcgacgccatatgatcgaaacatacaaccaaacttctccccgatctgcggccactggactgcccatcagcatgaaaatttttatgtatttacttactgtttttcttatcacccagatgattgggtcagcactttttgctgtgtatcttcatagaaggttggacaagatagaagatgaaaggaatcttcatgaagattttgtattcatgaaaacgatacagagatgcaacacaggagaaagatccttatccttactgaactgtgaggagattaaaagccagtttgaaggctttgtgaaggatataatgttaaacaaagaggagacgaagaaagaaaacagctttgaaatgcaaaaaggtgatcagaatcctcaaattgcggcacatgtcataagtgaggccagcagtaaaacaacatctgtgttacagtgggctgaaaaaggatactacaccatgagcaacaacttggtaaccctggaaaatgggaaacagctgaccgttaaaagacaaggactctattatatctatgcccaagtcaccttctgttccaatcgggaagcttcgagtcaagctccatttatagccagcctctgcctaaagtcccccggtagattcgagagaatcttactcagagctgcaaatacccacagttccgccaaaccttgcgggcaacaatccattcacttgggaggagtatttgaattgcaaccaggtgcttcggtgtttgtcaatgtgactgatccaagccaagtgagccatggcactggcttcacgtcctttggcttactcaaactctga

SEQ ID NO: 6650 - protein, 423 aa, Artificial Sequence
  Description of Artificial Sequence: Synthetic Construct
MSGISLIAALAVDRVIGMENAMPWNLPADLAWFKRNTLNKPVIMGRHTWESIGRPLPGRKNIILSSQPGTDDRVTWVKSVDEAIAACGDVPEIMVIGGGRVKEQFLPKAQKLYLTHIDAEVEGDTHFPDYEPDDWESVFSEFHDADAQNSHSYCFEILERRHMIETYNQTSPRSAATGLPISMKIFMYLLTVFLITQMIGSALFAVYLHRRLDKIEDERNLHEDFVFMKTIQRCNTGERSLSLLNCEEIKSQFEGFVKDIMLNKEETKKENSFEMQKGDQNPQIAAHVISEASSKTTSVLQWAEKGYYTMSNNLVTLENGKQLTVKRQGLYYIYAQVTFCSNREASSQAPFIASLCLKSPGRFERILLRAANTHSSAKPCGQQSIHLGGVFELQPGASVFVNVTDPSQVSHGTGFTSFGLLKL

SEQ ID NO: 6651 - DNA, 1272 bp, Artificial Sequence
  Description of Artificial Sequence: Synthetic Construct
atgtcagggatctcacttatcgcagccttggcagttgatcgtgtgatcggcatggaaaatgcgatgccatggaatcttccggccgacctcgcttggttcaaacgcaacaccctgaacaaacccgttattatgggccgacatacatgggaaagtatcggcaggccattgcccggtcggaaaaacataatcctttcctcccagccgggcacggacgatagagtgacttgggtcaaatcagttgacgaggccattgctgcctgcggcgatgtacccgagattatggttatcggaggtggccgagttaaagagcagtttctgcccaaagcgcagaagttgtaccttactcatatagatgcagaggtagagggcgacacgcatttccccgactacgaaccggatgattgggaatccgtattttccgaattccacgacgcggatgcccaaaacagtcactcttactgttttgaaattcttgagcgacgccatatgatcgaaacatacaaccaaacttctccccgatctgcggccactggactgcccatcagcatgaaaatttttatgtatttacttactgtttttcttatcacccagatgattgggtcagcactttttgctgtgtatcttcatagaaggttggacaagatagaagatgaaaggaatcttcatgaagattttgtattcatgaaaacgatacagagatgcaacacaggagaaagatccttatccttactgaactgtgaggagattaaaagccagtttgaaggctttgtgaaggatataatgttaaacaaagaggagacgaagaaagaaaacagctttgaaatgcaaaaaggtgatcagaatcctcaaattgcggcacatgtcataagtgaggccagcagtaaaacaacatctgtgttacagtgggctgaaaaaggatactacaccatgagcaacaacttggtaaccctggaaaatgggaaacagctgaccgttaaaagacaaggactctattatatctatgcccaagtcaccttctgttccaatcgggaagcttcgagtcaagctccatttatagccagcctctgcctaaagtcccccggtagattcgagagaatcttactcagagctgcaaatacccacagttccgccaaaccttgcgggcaacaatccattcacttgggaggagtatttgaattgcaaccaggtgcttcggtgtttgtcaatgtgactgatccaagccaagtgagccatggcactggcttcacgtcctttggcttactcaaactctga

SEQ ID NO: 6652 - protein, 423 aa, Artificial Sequence
  Description of Artificial Sequence: Synthetic Construct
MSGISLIAALAVDRVIGMENAMPWNLPADLAWFKRNTLNKPVIMGRHTWESIGRPLPGRKNIILSSQPGTDDRVTWVKSVDEAIAACGDVPEIMVIGGGRVLEQFLPKAQKLYLTHIDAEVEGDTHFPDYEPDDWESVFSEFHDADAQNSHSYCFEILERRHMIETYNQTSPRSAATGLPISMKIFMYLLTVFLITQMIGSALFAVYLHRRLDKIEDERNLHEDFVFMKTIQRCNTGERSLSLLNCEEIKSQFEGFVKDIMLNKEETKKENSFEMQKGDQNPQIAAHVISEASSKTTSVLQWAEKGYYTMSNNLVTLENGKQLTVKRQGLYYIYAQVTFCSNREASSQAPFIASLCLKSPGRFERILLRAANTHSSAKPCGQQSIHLGGVFELQPGASVFVNVTDPSQVSHGTGFTSFGLLKL

SEQ ID NO: 6653 - DNA, 1272 bp, Artificial Sequence
  Description of Artificial Sequence: Synthetic Construct
atgtcagggatctcacttatcgcagccttggcagttgatcgtgtgatcggcatggaaaatgcgatgccatggaatcttccggccgacctcgcttggttcaaacgcaacaccctgaacaaacccgttattatgggccgacatacatgggaaagtatcggcaggccattgcccggtcggaaaaacataatcctttcctcccagccgggcacggacgatagagtgacttgggtcaaatcagttgacgaggccattgctgcctgcggcgatgtacccgagattatggttatcggaggtggccgagttcttgagcagtttctgcccaaagcgcagaagttgtaccttactcatatagatgcagaggtagagggcgacacgcatttccccgactacgaaccggatgattgggaatccgtattttccgaattccacgacgcggatgcccaaaacagtcactcttactgttttgaaattcttgagcgacgccatatgatcgaaacatacaaccaaacttctccccgatctgcggccactggactgcccatcagcatgaaaatttttatgtatttacttactgtttttcttatcacccagatgattgggtcagcactttttgctgtgtatcttcatagaaggttggacaagatagaagatgaaaggaatcttcatgaagattttgtattcatgaaaacgatacagagatgcaacacaggagaaagatccttatccttactgaactgtgaggagattaaaagccagtttgaaggctttgtgaaggatataatgttaaacaaagaggagacgaagaaagaaaacagctttgaaatgcaaaaaggtgatcagaatcctcaaattgcggcacatgtcataagtgaggccagcagtaaaacaacatctgtgttacagtgggctgaaaaaggatactacaccatgagcaacaacttggtaaccctggaaaatgggaaacagctgaccgttaaaagacaaggactctattatatctatgcccaagtcaccttctgttccaatcgggaagcttcgagtcaagctccatttatagccagcctctgcctaaagtcccccggtagattcgagagaatcttactcagagctgcaaatacccacagttccgccaaaccttgcgggcaacaatccattcacttgggaggagtatttgaattgcaaccaggtgcttcggtgtttgtcaatgtgactgatccaagccaagtgagccatggcactggcttcacgtcctttggcttactcaaactctga

SEQ ID NO: 6654 - protein, 423 aa, Artificial Sequence
  Description of Artificial Sequence: Synthetic Construct
MSGISLIAALAVDRVIGMENAMPWNLPADLAWFKRNTLNKPVIMGRHTWESIGRPLPGRKNIILSSQPGTDDRVTWVKSVDEAIAACGDVPEIMVIGGGRVMEQFLPKAQKLYLTHIDAEVEGDTHFPDYEPDDWESVFSEFHDADAQNSHSYCFEILERRHMIETYNQTSPRSAATGLPISMKIFMYLLTVFLITQMIGSALFAVYLHRRLDKIEDERNLHEDFVFMKTIQRCNTGERSLSLLNCEEIKSQFEGFVKDIMLNKEETKKENSFEMQKGDQNPQIAAHVISEASSKTTSVLQWAEKGYYTMSNNLVTLENGKQLTVKRQGLYYIYAQVTFCSNREASSQAPFIASLCLKSPGRFERILLRAANTHSSAKPCGQQSIHLGGVFELQPGASVFVNVTDPSQVSHGTGFTSFGLLKL

SEQ ID NO: 6655 - DNA, 1272 bp, Artificial Sequence
  Description of Artificial Sequence: Synthetic Construct
atgtcagggatctcacttatcgcagccttggcagttgatcgtgtgatcggcatggaaaatgcgatgccatggaatcttccggccgacctcgcttggttcaaacgcaacaccctgaacaaacccgttattatgggccgacatacatgggaaagtatcggcaggccattgcccggtcggaaaaacataatcctttcctcccagccgggcacggacgatagagtgacttgggtcaaatcagttgacgaggccattgctgcctgcggcgatgtacccgagattatggttatcggaggtggccgagttatggagcagtttctgcccaaagcgcagaagttgtaccttactcatatagatgcagaggtagagggcgacacgcatttccccgactacgaaccggatgattgggaatccgtattttccgaattccacgacgcggatgcccaaaacagtcactcttactgttttgaaattcttgagcgacgccatatgatcgaaacatacaaccaaacttctccccgatctgcggccactggactgcccatcagcatgaaaatttttatgtatttacttactgtttttcttatcacccagatgattgggtcagcactttttgctgtgtatcttcatagaaggttggacaagatagaagatgaaaggaatcttcatgaagattttgtattcatgaaaacgatacagagatgcaacacaggagaaagatccttatccttactgaactgtgaggagattaaaagccagtttgaaggctttgtgaaggatataatgttaaacaaagaggagacgaagaaagaaaacagctttgaaatgcaaaaaggtgatcagaatcctcaaattgcggcacatgtcataagtgaggccagcagtaaaacaacatctgtgttacagtgggctgaaaaaggatactacaccatgagcaacaacttggtaaccctggaaaatgggaaacagctgaccgttaaaagacaaggactctattatatctatgcccaagtcaccttctgttccaatcgggaagcttcgagtcaagctccatttatagccagcctctgcctaaagtcccccggtagattcgagagaatcttactcagagctgcaaatacccacagttccgccaaaccttgcgggcaacaatccattcacttgggaggagtatttgaattgcaaccaggtgcttcggtgtttgtcaatgtgactgatccaagccaagtgagccatggcactggcttcacgtcctttggcttactcaaactctga

SEQ ID NO: 6656 - protein, 423 aa, Artificial Sequence
  Description of Artificial Sequence: Synthetic Construct
MSGISLIAALAVDRVIGMENAMPWNLPADLAWFKRNTLNKPVIMGRHTWESIGRPLPGRKNIILSSQPGTDDRVTWVKSVDEAIAACGDVPEIMVIGGGRVNEQFLPKAQKLYLTHIDAEVEGDTHFPDYEPDDWESVFSEFHDADAQNSHSYCFEILERRHMIETYNQTSPRSAATGLPISMKIFMYLLTVFLITQMIGSALFAVYLHRRLDKIEDERNLHEDFVFMKTIQRCNTGERSLSLLNCEEIKSQFEGFVKDIMLNKEETKKENSFEMQKGDQNPQIAAHVISEASSKTTSVLQWAEKGYYTMSNNLVTLENGKQLTVKRQGLYYIYAQVTFCSNREASSQAPFIASLCLKSPGRFERILLRAANTHSSAKPCGQQSIHLGGVFELQPGASVFVNVTDPSQVSHGTGFTSFGLLKL

SEQ ID NO: 6657 - DNA, 1272 bp, Artificial Sequence
  Description of Artificial Sequence: Synthetic Construct
atgtcagggatctcacttatcgcagccttggcagttgatcgtgtgatcggcatggaaaatgcgatgccatggaatcttccggccgacctcgcttggttcaaacgcaacaccctgaacaaacccgttattatgggccgacatacatgggaaagtatcggcaggccattgcccggtcggaaaaacataatcctttcctcccagccgggcacggacgatagagtgacttgggtcaaatcagttgacgaggccattgctgcctgcggcgatgtacccgagattatggttatcggaggtggccgagttaacgagcagtttctgcccaaagcgcagaagttgtaccttactcatatagatgcagaggtagagggcgacacgcatttccccgactacgaaccggatgattgggaatccgtattttccgaattccacgacgcggatgcccaaaacagtcactcttactgttttgaaattcttgagcgacgccatatgatcgaaacatacaaccaaacttctccccgatctgcggccactggactgcccatcagcatgaaaatttttatgtatttacttactgtttttcttatcacccagatgattgggtcagcactttttgctgtgtatcttcatagaaggttggacaagatagaagatgaaaggaatcttcatgaagattttgtattcatgaaaacgatacagagatgcaacacaggagaaagatccttatccttactgaactgtgaggagattaaaagccagtttgaaggctttgtgaaggatataatgttaaacaaagaggagacgaagaaagaaaacagctttgaaatgcaaaaaggtgatcagaatcctcaaattgcggcacatgtcataagtgaggccagcagtaaaacaacatctgtgttacagtgggctgaaaaaggatactacaccatgagcaacaacttggtaaccctggaaaatgggaaacagctgaccgttaaaagacaaggactctattatatctatgcccaagtcaccttctgttccaatcgggaagcttcgagtcaagctccatttatagccagcctctgcctaaagtcccccggtagattcgagagaatcttactcagagctgcaaatacccacagttccgccaaaccttgcgggcaacaatccattcacttgggaggagtatttgaattgcaaccaggtgcttcggtgtttgtcaatgtgactgatccaagccaagtgagccatggcactggcttcacgtcctttggcttactcaaactctga

SEQ ID NO: 6658 - protein, 423 aa, Artificial Sequence
  Description of Artificial Sequence: Synthetic Construct
MSGISLIAALAVDRVIGMENAMPWNLPADLAWFKRNTLNKPVIMGRHTWESIGRPLPGRKNIILSSQPGTDDRVTWVKSVDEAIAACGDVPEIMVIGGGRVPEQFLPKAQKLYLTHIDAEVEGDTHFPDYEPDDWESVFSEFHDADAQNSHSYCFEILERRHMIETYNQTSPRSAATGLPISMKIFMYLLTVFLITQMIGSALFAVYLHRRLDKIEDERNLHEDFVFMKTIQRCNTGERSLSLLNCEEIKSQFEGFVKDIMLNKEETKKENSFEMQKGDQNPQIAAHVISEASSKTTSVLQWAEKGYYTMSNNLVTLENGKQLTVKRQGLYYIYAQVTFCSNREASSQAPFIASLCLKSPGRFERILLRAANTHSSAKPCGQQSIHLGGVFELQPGASVFVNVTDPSQVSHGTGFTSFGLLKL

SEQ ID NO: 6659 - DNA, 1272 bp, Artificial Sequence
  Description of Artificial Sequence: Synthetic Construct
atgtcagggatctcacttatcgcagccttggcagttgatcgtgtgatcggcatggaaaatgcgatgccatggaatcttccggccgacctcgcttggttcaaacgcaacaccctgaacaaacccgttattatgggccgacatacatgggaaagtatcggcaggccattgcccggtcggaaaaacataatcctttcctcccagccgggcacggacgatagagtgacttgggtcaaatcagttgacgaggccattgctgcctgcggcgatgtacccgagattatggttatcggaggtggccgagttcccgagcagtttctgcccaaagcgcagaagttgtaccttactcatatagatgcagaggtagagggcgacacgcatttccccgactacgaaccggatgattgggaatccgtattttccgaattccacgacgcggatgcccaaaacagtcactcttactgttttgaaattcttgagcgacgccatatgatcgaaacatacaaccaaacttctccccgatctgcggccactggactgcccatcagcatgaaaatttttatgtatttacttactgtttttcttatcacccagatgattgggtcagcactttttgctgtgtatcttcatagaaggttggacaagatagaagatgaaaggaatcttcatgaagattttgtattcatgaaaacgatacagagatgcaacacaggagaaagatccttatccttactgaactgtgaggagattaaaagccagtttgaaggctttgtgaaggatataatgttaaacaaagaggagacgaagaaagaaaacagctttgaaatgcaaaaaggtgatcagaatcctcaaattgcggcacatgtcataagtgaggccagcagtaaaacaacatctgtgttacagtgggctgaaaaaggatactacaccatgagcaacaacttggtaaccctggaaaatgggaaacagctgaccgttaaaagacaaggactctattatatctatgcccaagtcaccttctgttccaatcgggaagcttcgagtcaagctccatttatagccagcctctgcctaaagtcccccggtagattcgagagaatcttactcagagctgcaaatacccacagttccgccaaaccttgcgggcaacaatccattcacttgggaggagtatttgaattgcaaccaggtgcttcggtgtttgtcaatgtgactgatccaagccaagtgagccatggcactggcttcacgtcctttggcttactcaaactctga

SEQ ID NO: 6660 - protein, 423 aa, Artificial Sequence
  Description of Artificial Sequence: Synthetic Construct
MSGISLIAALAVDRVIGMENAMPWNLPADLAWFKRNTLNKPVIMGRHTWESIGRPLPGRKNIILSSQPGTDDRVTWVKSVDEAIAACGDVPEIMVIGGGRVQEQFLPKAQKLYLTHIDAEVEGDTHFPDYEPDDWESVFSEFHDADAQNSHSYCFEILERRHMIETYNQTSPRSAATGLPISMKIFMYLLTVFLITQMIGSALFAVYLHRRLDKIEDERNLHEDFVFMKTIQRCNTGERSLSLLNCEEIKSQFEGFVKDIMLNKEETKKENSFEMQKGDQNPQIAAHVISEASSKTTSVLQWAEKGYYTMSNNLVTLENGKQLTVKRQGLYYIYAQVTFCSNREASSQAPFIASLCLKSPGRFERILLRAANTHSSAKPCGQQSIHLGGVFELQPGASVFVNVTDPSQVSHGTGFTSFGLLKL

SEQ ID NO: 6661 - DNA, 1272 bp, Artificial Sequence
  Description of Artificial Sequence: Synthetic Construct
atgtcagggatctcacttatcgcagccttggcagttgatcgtgtgatcggcatggaaaatgcgatgccatggaatcttccggccgacctcgcttggttcaaacgcaacaccctgaacaaacccgttattatgggccgacatacatgggaaagtatcggcaggccattgcccggtcggaaaaacataatcctttcctcccagccgggcacggacgatagagtgacttgggtcaaatcagttgacgaggccattgctgcctgcggcgatgtacccgagattatggttatcggaggtggccgagttcaagagcagtttctgcccaaagcgcagaagttgtaccttactcatatagatgcagaggtagagggcgacacgcatttccccgactacgaaccggatgattgggaatccgtattttccgaattccacgacgcggatgcccaaaacagtcactcttactgttttgaaattcttgagcgacgccatatgatcgaaacatacaaccaaacttctccccgatctgcggccactggactgcccatcagcatgaaaatttttatgtatttacttactgtttttcttatcacccagatgattgggtcagcactttttgctgtgtatcttcatagaaggttggacaagatagaagatgaaaggaatcttcatgaagattttgtattcatgaaaacgatacagagatgcaacacaggagaaagatccttatccttactgaactgtgaggagattaaaagccagtttgaaggctttgtgaaggatataatgttaaacaaagaggagacgaagaaagaaaacagctttgaaatgcaaaaaggtgatcagaatcctcaaattgcggcacatgtcataagtgaggccagcagtaaaacaacatctgtgttacagtgggctgaaaaaggatactacaccatgagcaacaacttggtaaccctggaaaatgggaaacagctgaccgttaaaagacaaggactctattatatctatgcccaagtcaccttctgttccaatcgggaagcttcgagtcaagctccatttatagccagcctctgcctaaagtcccccggtagattcgagagaatcttactcagagctgcaaatacccacagttccgccaaaccttgcgggcaacaatccattcacttgggaggagtatttgaattgcaaccaggtgcttcggtgtttgtcaatgtgactgatccaagccaagtgagccatggcactggcttcacgtcctttggcttactcaaactctga

SEQ ID NO: 6662 - protein, 423 aa, Artificial Sequence
  Description of Artificial Sequence: Synthetic Construct
MSGISLIAALAVDRVIGMENAMPWNLPADLAWFKRNTLNKPVIMGRHTWESIGRPLPGRKNIILSSQPGTDDRVTWVKSVDEAIAACGDVPEIMVIGGGRVREQFLPKAQKLYLTHIDAEVEGDTHFPDYEPDDWESVFSEFHDADAQNSHSYCFEILERRHMIETYNQTSPRSAATGLPISMKIFMYLLTVFLITQMIGSALFAVYLHRRLDKIEDERNLHEDFVFMKTIQRCNTGERSLSLLNCEEIKSQFEGFVKDIMLNKEETKKENSFEMQKGDQNPQIAAHVISEASSKTTSVLQWAEKGYYTMSNNLVTLENGKQLTVKRQGLYYIYAQVTFCSNREASSQAPFIASLCLKSPGRFERILLRAANTHSSAKPCGQQSIHLGGVFELQPGASVFVNVTDPSQVSHGTGFTSFGLLKL

SEQ ID NO: 6663 - DNA, 1272 bp, Artificial Sequence
  Description of Artificial Sequence: Synthetic Construct
atgtcagggatctcacttatcgcagccttggcagttgatcgtgtgatcggcatggaaaatgcgatgccatggaatcttccggccgacctcgcttggttcaaacgcaacaccctgaacaaacccgttattatgggccgacatacatgggaaagtatcggcaggccattgcccggtcggaaaaacataatcctttcctcccagccgggcacggacgatagagtgacttgggtcaaatcagttgacgaggccattgctgcctgcggcgatgtacccgagattatggttatcggaggtggccgagttagagagcagtttctgcccaaagcgcagaagttgtaccttactcatatagatgcagaggtagagggcgacacgcatttccccgactacgaaccggatgattgggaatccgtattttccgaattccacgacgcggatgcccaaaacagtcactcttactgttttgaaattcttgagcgacgccatatgatcgaaacatacaaccaaacttctccccgatctgcggccactggactgcccatcagcatgaaaatttttatgtatttacttactgtttttcttatcacccagatgattgggtcagcactttttgctgtgtatcttcatagaaggttggacaagatagaagatgaaaggaatcttcatgaagattttgtattcatgaaaacgatacagagatgcaacacaggagaaagatccttatccttactgaactgtgaggagattaaaagccagtttgaaggctttgtgaaggatataatgttaaacaaagaggagacgaagaaagaaaacagctttgaaatgcaaaaaggtgatcagaatcctcaaattgcggcacatgtcataagtgaggccagcagtaaaacaacatctgtgttacagtgggctgaaaaaggatactacaccatgagcaacaacttggtaaccctggaaaatgggaaacagctgaccgttaaaagacaaggactctattatatctatgcccaagtcaccttctgttccaatcgggaagcttcgagtcaagctccatttatagccagcctctgcctaaagtcccccggtagattcgagagaatcttactcagagctgcaaatacccacagttccgccaaaccttgcgggcaacaatccattcacttgggaggagtatttgaattgcaaccaggtgcttcggtgtttgtcaatgtgactgatccaagccaagtgagccatggcactggcttcacgtcctttggcttactcaaactctga

SEQ ID NO: 6664 - protein, 423 aa, Artificial Sequence
  Description of Artificial Sequence: Synthetic Construct
MSGISLIAALAVDRVIGMENAMPWNLPADLAWFKRNTLNKPVIMGRHTWESIGRPLPGRKNIILSSQPGTDDRVTWVKSVDEAIAACGDVPEIMVIGGGRVSEQFLPKAQKLYLTHIDAEVEGDTHFPDYEPDDWESVFSEFHDADAQNSHSYCFEILERRHMIETYNQTSPRSAATGLPISMKIFMYLLTVFLITQMIGSALFAVYLHRRLDKIEDERNLHEDFVFMKTIQRCNTGERSLSLLNCEEIKSQFEGFVKDIMLNKEETKKENSFEMQKGDQNPQIAAHVISEASSKTTSVLQWAEKGYYTMSNNLVTLENGKQLTVKRQGLYYIYAQVTFCSNREASSQAPFIASLCLKSPGRFERILLRAANTHSSAKPCGQQSIHLGGVFELQPGASVFVNVTDPSQVSHGTGFTSFGLLKL

SEQ ID NO: 6665 - DNA, 1272 bp, Artificial Sequence
  Description of Artificial Sequence: Synthetic Construct
atgtcagggatctcacttatcgcagccttggcagttgatcgtgtgatcggcatggaaaatgcgatgccatggaatcttccggccgacctcgcttggttcaaacgcaacaccctgaacaaacccgttattatgggccgacatacatgggaaagtatcggcaggccattgcccggtcggaaaaacataatcctttcctcccagccgggcacggacgatagagtgacttgggtcaaatcagttgacgaggccattgctgcctgcggcgatgtacccgagattatggttatcggaggtggccgagtttccgagcagtttctgcccaaagcgcagaagttgtaccttactcatatagatgcagaggtagagggcgacacgcatttccccgactacgaaccggatgattgggaatccgtattttccgaattccacgacgcggatgcccaaaacagtcactcttactgttttgaaattcttgagcgacgccatatgatcgaaacatacaaccaaacttctccccgatctgcggccactggactgcccatcagcatgaaaatttttatgtatttacttactgtttttcttatcacccagatgattgggtcagcactttttgctgtgtatcttcatagaaggttggacaagatagaagatgaaaggaatcttcatgaagattttgtattcatgaaaacgatacagagatgcaacacaggagaaagatccttatccttactgaactgtgaggagattaaaagccagtttgaaggctttgtgaaggatataatgttaaacaaagaggagacgaagaaagaaaacagctttgaaatgcaaaaaggtgatcagaatcctcaaattgcggcacatgtcataagtgaggccagcagtaaaacaacatctgtgttacagtgggctgaaaaaggatactacaccatgagcaacaacttggtaaccctggaaaatgggaaacagctgaccgttaaaagacaaggactctattatatctatgcccaagtcaccttctgttccaatcgggaagcttcgagtcaagctccatttatagccagcctctgcctaaagtcccccggtagattcgagagaatcttactcagagctgcaaatacccacagttccgccaaaccttgcgggcaacaatccattcacttgggaggagtatttgaattgcaaccaggtgcttcggtgtttgtcaatgtgactgatccaagccaagtgagccatggcactggcttcacgtcctttggcttactcaaactctga

SEQ ID NO: 6666 - protein, 423 aa, Artificial Sequence
  Description of Artificial Sequence: Synthetic Construct
MSGISLIAALAVDRVIGMENAMPWNLPADLAWFKRNTLNKPVIMGRHTWESIGRPLPGRKNIILSSQPGTDDRVTWVKSVDEAIAACGDVPEIMVIGGGRVTEQFLPKAQKLYLTHIDAEVEGDTHFPDYEPDDWESVFSEFHDADAQNSHSYCFEILERRHMIETYNQTSPRSAATGLPISMKIFMYLLTVFLITQMIGSALFAVYLHRRLDKIEDERNLHEDFVFMKTIQRCNTGERSLSLLNCEEIKSQFEGFVKDIMLNKEETKKENSFEMQKGDQNPQIAAHVISEASSKTTSVLQWAEKGYYTMSNNLVTLENGKQLTVKRQGLYYIYAQVTFCSNREASSQAPFIASLCLKSPGRFERILLRAANTHSSAKPCGQQSIHLGGVFELQPGASVFVNVTDPSQVSHGTGFTSFGLLKL

SEQ ID NO: 6667 - DNA, 1272 bp, Artificial Sequence
  Description of Artificial Sequence: Synthetic Construct
atgtcagggatctcacttatcgcagccttggcagttgatcgtgtgatcggcatggaaaatgcgatgccatggaatcttccggccgacctcgcttggttcaaacgcaacaccctgaacaaacccgttattatgggccgacatacatgggaaagtatcggcaggccattgcccggtcggaaaaacataatcctttcctcccagccgggcacggacgatagagtgacttgggtcaaatcagttgacgaggccattgctgcctgcggcgatgtacccgagattatggttatcggaggtggccgagttaccgagcagtttctgcccaaagcgcagaagttgtaccttactcatatagatgcagaggtagagggcgacacgcatttccccgactacgaaccggatgattgggaatccgtattttccgaattccacgacgcggatgcccaaaacagtcactcttactgttttgaaattcttgagcgacgccatatgatcgaaacatacaaccaaacttctccccgatctgcggccactggactgcccatcagcatgaaaatttttatgtatttacttactgtttttcttatcacccagatgattgggtcagcactttttgctgtgtatcttcatagaaggttggacaagatagaagatgaaaggaatcttcatgaagattttgtattcatgaaaacgatacagagatgcaacacaggagaaagatccttatccttactgaactgtgaggagattaaaagccagtttgaaggctttgtgaaggatataatgttaaacaaagaggagacgaagaaagaaaacagctttgaaatgcaaaaaggtgatcagaatcctcaaattgcggcacatgtcataagtgaggccagcagtaaaacaacatctgtgttacagtgggctgaaaaaggatactacaccatgagcaacaacttggtaaccctggaaaatgggaaacagctgaccgttaaaagacaaggactctattatatctatgcccaagtcaccttctgttccaatcgggaagcttcgagtcaagctccatttatagccagcctctgcctaaagtcccccggtagattcgagagaatcttactcagagctgcaaatacccacagttccgccaaaccttgcgggcaacaatccattcacttgggaggagtatttgaattgcaaccaggtgcttcggtgtttgtcaatgtgactgatccaagccaagtgagccatggcactggcttcacgtcctttggcttactcaaactctga

SEQ ID NO: 6668 - protein, 423 aa, Artificial Sequence
  Description of Artificial Sequence: Synthetic Construct
MSGISLIAALAVDRVIGMENAMPWNLPADLAWFKRNTLNKPVIMGRHTWESIGRPLPGRKNIILSSQPGTDDRVTWVKSVDEAIAACGDVPEIMVIGGGRVVEQFLPKAQKLYLTHIDAEVEGDTHFPDYEPDDWESVFSEFHDADAQNSHSYCFEILERRHMIETYNQTSPRSAATGLPISMKIFMYLLTVFLITQMIGSALFAVYLHRRLDKIEDERNLHEDFVFMKTIQRCNTGERSLSLLNCEEIKSQFEGFVKDIMLNKEETKKENSFEMQKGDQNPQIAAHVISEASSKTTSVLQWAEKGYYTMSNNLVTLENGKQLTVKRQGLYYIYAQVTFCSNREASSQAPFIASLCLKSPGRFERILLRAANTHSSAKPCGQQSIHLGGVFELQPGASVFVNVTDPSQVSHGTGFTSFGLLKL

SEQ ID NO: 6669 - DNA, 1272 bp, Artificial Sequence
  Description of Artificial Sequence: Synthetic Construct
atgtcagggatctcacttatcgcagccttggcagttgatcgtgtgatcggcatggaaaatgcgatgccatggaatcttccggccgacctcgcttggttcaaacgcaacaccctgaacaaacccgttattatgggccgacatacatgggaaagtatcggcaggccattgcccggtcggaaaaacataatcctttcctcccagccgggcacggacgatagagtgacttgggtcaaatcagttgacgaggccattgctgcctgcggcgatgtacccgagattatggttatcggaggtggccgagttgtggagcagtttctgcccaaagcgcagaagttgtaccttactcatatagatgcagaggtagagggcgacacgcatttccccgactacgaaccggatgattgggaatccgtattttccgaattccacgacgcggatgcccaaaacagtcactcttactgttttgaaattcttgagcgacgccatatgatcgaaacatacaaccaaacttctccccgatctgcggccactggactgcccatcagcatgaaaatttttatgtatttacttactgtttttcttatcacccagatgattgggtcagcactttttgctgtgtatcttcatagaaggttggacaagatagaagatgaaaggaatcttcatgaagattttgtattcatgaaaacgatacagagatgcaacacaggagaaagatccttatccttactgaactgtgaggagattaaaagccagtttgaaggctttgtgaaggatataatgttaaacaaagaggagacgaagaaagaaaacagctttgaaatgcaaaaaggtgatcagaatcctcaaattgcggcacatgtcataagtgaggccagcagtaaaacaacatctgtgttacagtgggctgaaaaaggatactacaccatgagcaacaacttggtaaccctggaaaatgggaaacagctgaccgttaaaagacaaggactctattatatctatgcccaagtcaccttctgttccaatcgggaagcttcgagtcaagctccatttatagccagcctctgcctaaagtcccccggtagattcgagagaatcttactcagagctgcaaatacccacagttccgccaaaccttgcgggcaacaatccattcacttgggaggagtatttgaattgcaaccaggtgcttcggtgtttgtcaatgtgactgatccaagccaagtgagccatggcactggcttcacgtcctttggcttactcaaactctga

SEQ ID NO: 6670 - protein, 423 aa, Artificial Sequence
  Description of Artificial Sequence: Synthetic Construct
MSGISLIAALAVDRVIGMENAMPWNLPADLAWFKRNTLNKPVIMGRHTWESIGRPLPGRKNIILSSQPGTDDRVTWVKSVDEAIAACGDVPEIMVIGGGRVWEQFLPKAQKLYLTHIDAEVEGDTHFPDYEPDDWESVFSEFHDADAQNSHSYCFEILERRHMIETYNQTSPRSAATGLPISMKIFMYLLTVFLITQMIGSALFAVYLHRRLDKIEDERNLHEDFVFMKTIQRCNTGERSLSLLNCEEIKSQFEGFVKDIMLNKEETKKENSFEMQKGDQNPQIAAHVISEASSKTTSVLQWAEKGYYTMSNNLVTLENGKQLTVKRQGLYYIYAQVTFCSNREASSQAPFIASLCLKSPGRFERILLRAANTHSSAKPCGQQSIHLGGVFELQPGASVFVNVTDPSQVSHGTGFTSFGLLKL

SEQ ID NO: 6671 - DNA, 1272 bp, Artificial Sequence
  Description of Artificial Sequence: Synthetic Construct
atgtcagggatctcacttatcgcagccttggcagttgatcgtgtgatcggcatggaaaatgcgatgccatggaatcttccggccgacctcgcttggttcaaacgcaacaccctgaacaaacccgttattatgggccgacatacatgggaaagtatcggcaggccattgcccggtcggaaaaacataatcctttcctcccagccgggcacggacgatagagtgacttgggtcaaatcagttgacgaggccattgctgcctgcggcgatgtacccgagattatggttatcggaggtggccgagtttgggagcagtttctgcccaaagcgcagaagttgtaccttactcatatagatgcagaggtagagggcgacacgcatttccccgactacgaaccggatgattgggaatccgtattttccgaattccacgacgcggatgcccaaaacagtcactcttactgttttgaaattcttgagcgacgccatatgatcgaaacatacaaccaaacttctccccgatctgcggccactggactgcccatcagcatgaaaatttttatgtatttacttactgtttttcttatcacccagatgattgggtcagcactttttgctgtgtatcttcatagaaggttggacaagatagaagatgaaaggaatcttcatgaagattttgtattcatgaaaacgatacagagatgcaacacaggagaaagatccttatccttactgaactgtgaggagattaaaagccagtttgaaggctttgtgaaggatataatgttaaacaaagaggagacgaagaaagaaaacagctttgaaatgcaaaaaggtgatcagaatcctcaaattgcggcacatgtcataagtgaggccagcagtaaaacaacatctgtgttacagtgggctgaaaaaggatactacaccatgagcaacaacttggtaaccctggaaaatgggaaacagctgaccgttaaaagacaaggactctattatatctatgcccaagtcaccttctgttccaatcgggaagcttcgagtcaagctccatttatagccagcctctgcctaaagtcccccggtagattcgagagaatcttactcagagctgcaaatacccacagttccgccaaaccttgcgggcaacaatccattcacttgggaggagtatttgaattgcaaccaggtgcttcggtgtttgtcaatgtgactgatccaagccaagtgagccatggcactggcttcacgtcctttggcttactcaaactctga

SEQ ID NO: 6672 - protein, 423 aa, Artificial Sequence
  Description of Artificial Sequence: Synthetic Construct
MSGISLIAALAVDRVIGMENAMPWNLPADLAWFKRNTLNKPVIMGRHTWESIGRPLPGRKNIILSSQPGTDDRVTWVKSVDEAIAACGDVPEIMVIGGGRVYEQFLPKAQKLYLTHIDAEVEGDTHFPDYEPDDWESVFSEFHDADAQNSHSYCFEILERRHMIETYNQTSPRSAATGLPISMKIFMYLLTVFLITQMIGSALFAVYLHRRLDKIEDERNLHEDFVFMKTIQRCNTGERSLSLLNCEEIKSQFEGFVKDIMLNKEETKKENSFEMQKGDQNPQIAAHVISEASSKTTSVLQWAEKGYYTMSNNLVTLENGKQLTVKRQGLYYIYAQVTFCSNREASSQAPFIASLCLKSPGRFERILLRAANTHSSAKPCGQQSIHLGGVFELQPGASVFVNVTDPSQVSHGTGFTSFGLLKL

SEQ ID NO: 6673 - DNA, 1272 bp, Artificial Sequence
  Description of Artificial Sequence: Synthetic Construct
atgtcagggatctcacttatcgcagccttggcagttgatcgtgtgatcggcatggaaaatgcgatgccatggaatcttccggccgacctcgcttggttcaaacgcaacaccctgaacaaacccgttattatgggccgacatacatgggaaagtatcggcaggccattgcccggtcggaaaaacataatcctttcctcccagccgggcacggacgatagagtgacttgggtcaaatcagttgacgaggccattgctgcctgcggcgatgtacccgagattatggttatcggaggtggccgagtttatgagcagtttctgcccaaagcgcagaagttgtaccttactcatatagatgcagaggtagagggcgacacgcatttccccgactacgaaccggatgattgggaatccgtattttccgaattccacgacgcggatgcccaaaacagtcactcttactgttttgaaattcttgagcgacgccatatgatcgaaacatacaaccaaacttctccccgatctgcggccactggactgcccatcagcatgaaaatttttatgtatttacttactgtttttcttatcacccagatgattgggtcagcactttttgctgtgtatcttcatagaaggttggacaagatagaagatgaaaggaatcttcatgaagattttgtattcatgaaaacgatacagagatgcaacacaggagaaagatccttatccttactgaactgtgaggagattaaaagccagtttgaaggctttgtgaaggatataatgttaaacaaagaggagacgaagaaagaaaacagctttgaaatgcaaaaaggtgatcagaatcctcaaattgcggcacatgtcataagtgaggccagcagtaaaacaacatctgtgttacagtgggctgaaaaaggatactacaccatgagcaacaacttggtaaccctggaaaatgggaaacagctgaccgttaaaagacaaggactctattatatctatgcccaagtcaccttctgttccaatcgggaagcttcgagtcaagctccatttatagccagcctctgcctaaagtcccccggtagattcgagagaatcttactcagagctgcaaatacccacagttccgccaaaccttgcgggcaacaatccattcacttgggaggagtatttgaattgcaaccaggtgcttcggtgtttgtcaatgtgactgatccaagccaagtgagccatggcactggcttcacgtcctttggcttactcaaactctga

SEQ ID NO: 6674 - protein, 261 aa, Artificial Sequence
  Description of Artificial Sequence: Synthetic Construct
MIETYNQTSPRSAATGLPISMKIFMYLLTVFLITQMIGSALFAVYLHRRLDKIEDERNLHEDFVFMKTIQRCNTGERSLSLLNCEEIKSQFEGFVKDIMLNKEETKKENGGSGGSGDQNPQIAAHVISEASSKTTSVLQWAEKGYYTMSNNLVTLENGKQLTVKRQGLYYIYAQVTFCSNREASSQAPFIASLCLKSPGRFERILLRAANTHSSAKPCGQQSIHLGGVFELQPGASVFVNVTDPSQVSHGTGFTSFGLLKL

SEQ ID NO: 6675 - DNA, 783 bp, Artificial Sequence
  Description of Artificial Sequence: Synthetic Construct
atgatcgaaacatacaaccaaacttctccccgatctgcggccactggactgcccatcagcatgaaaatttttatgtatttacttactgtttttcttatcacccagatgattgggtcagcactttttgctgtgtatcttcatagaaggttggacaagatagaagatgaaaggaatcttcatgaagattttgtattcatgaaaacgatacagagatgcaacacaggagaaagatccttatccttactgaactgtgaggagattaaaagccagtttgaaggctttgtgaaggatataatgttaaacaaagaggagacgaagaaagaaaacggtggaagtggtggaagtggtgatcagaatcctcaaattgcggcacatgtcataagtgaggccagcagtaaaacaacatctgtgttacagtgggctgaaaaaggatactacaccatgagcaacaacttggtaaccctggaaaatgggaaacagctgaccgttaaaagacaaggactctattatatctatgcccaagtcaccttctgttccaatcgggaagcttcgagtcaagctccatttatagccagcctctgcctaaagtcccccggtagattcgagagaatcttactcagagctgcaaatacccacagttccgccaaaccttgcgggcaacaatccattcacttgggaggagtatttgaattgcaaccaggtgcttcggtgtttgtcaatgtgactgatccaagccaagtgagccatggcactggcttcacgtcctttggcttactcaaactc
